United States Patent Application Publication US 2017/0335317 A1 - sequence listing, part 4

SEQ ID NO: 8123 - DNA, 4772 bp, mus musculus
gtcagagttcacatccagcggcctcgcagtagaggtggcggcaaggggactggtggtcagcccccgaggctggaggagcctggcctggggggcctgagcaccctgagtcggagagcccgcttcaggtatctttggttccaaccatgaggagggcccagcagggggaggctgccagcgagcctcagacctcatgcctgcgatcttccctaccctggtgctcccaggccccctgctcgcagcccagacccttgcctctgcaccccacctaggagagaggcttccccattccccttcctgcccatgggaggggtgtagctcttcccagttggtccctgctcttctgcagtgagtggggcaggtggcaaagccagaggggagcagtgatttgtctttgcttggcccctgccaccttcctggaccttttaaaaatacaccggggtgcgatgggagagaaagtaggcacccgggagctgcgtggatgcagccagctctgagcctgagcctgagcggggttcgccactggttcgcctgccgtctgctctgctgctatcagctgagatgctgctttgttccttggtttgctcagcaactgggagagaggactcagcttctcttgagagcacagtcccagatggcagccgtagattagctaaatgcagttactttgcagatgaggaaactgagacctggggacgttctgagtggatggcagtgtggtctcctgctggctaccctgggcctcaggagcatttgctaggcctaggcacagacagggtggggtgggccttgtttaggcgcaggaggccagggttgtggtggaaaggcccgtccagcctctgcggctctggtgaagctgagcccctgctgagtgccctgcatttgtgctgggagggtggggagaggccggatcacagagaggctggatgcagaaaggaggggcttgggtctcgtgtgtgtgtgtgtgtgtgtgtgtgtgtgtgtgtgtgtgtgtgtccacctttgctgaaaggaggggcttgggatgggtgtgtgtgtgtgtgtgtgtgtgtgtctgtctgtgcagccccagcagagcagacaggtggcttgagagcttgtggtggggaggttttgttcacaaacctgtggatgggttttcagaacctggcctgttatagaaagaccatgcagatggatggagccgtagctgtgtggtggtggtaggcggagtgtaaatgctccctttgagatcttgtctggccttggccccgtaatttagcagatgaggaaagggggggcctggaaccatgaaaaggatatcccagatcctgcaaaggatggtagcggaagactcagcaaatggttacccagctggctgggtcgtagctcctcagcgctatgtgctgccgtgccagtgcctgtgtggcagagctggcccctggggcccactctcctgggctgcggaggctgagggatgtgaggcaggccctacaccctgctctccccttcctgggcccaggtgcttgggcctggaggcccttgctgggagctgctgcagctgagaggtgccccgcagctgggcctgactctcctcttgcggctgcccccacattcccagtcctccccagctggctggcgggtgggagagcctgggaaatgagtccgctagccagaggcagccaagcccctgaatcagaatggggttgggacgagggggcacagccagtgcttgctgggctccatcacccccatggagaggcagcttgccaagggtgggtagacaggaggaatcctgccctgggtgcaggtggcagcctcctgggtcctgcccagagcctggccactgacctggctgtgcatggacctgtgccctgcaggttgcacttcccccagctggccctgaggcggaggctggggcagctgagctgcatgtccagacccgctctgaaactgcgctcctggcccttgaccgtcctctactacctcctgcccttcggcgccctcagaccgctcagccgggtgggatggaggcccgtaagcagggtaagtgtgcacaggcccctgtggctcggacctcccttccgggcaggcctgaggttggggtgcaggagagactgaggtggtggcgagctgtcagaagcagaggtcaccgctacatcttcagggggtccgggtcggaaggttcattggtgggcaaggccaaggcagcttttgagaaggccactacctgggccgcgggtgactgcgagggcatgtcgtgccctgcccactcccctagcctgcctcatgtctgccatttggggctctggttctggaaggaacccagtctggggattcagaaaatggtgtctgtctctgatttttctgtgttcaagcaaaaaagagcttataggtgattttgaacagaagccaaattaattccgggatgccaaaggggtggttcaggatggatggatcctgtttgggtcccttagggtgaggacacccttaaggaacccagaggcatgccccaggaatgggcaagggaactggcttgtcctctcctggtccctagagggcttgctcttgcccttggcttcccaggcaggttgaccccaaggaggaaaccctgttcctgggcctttgacagtcacatgggtgtcatcagagctcaggggcactgaggcaccctggacattagcccaggctcccacctgtgcctgggaagggcctgggctcacatagcccttctgtgtgactgggcatcagctggaagggataagagcagctctctgggagcttaccttaccttggagaggtgttgaaagttggaatgaaatcagttttacaccttggggagttggtgtcttggttgtgtttagagaagcagcagccaccaattacaggcagcttctacagtggcagcagcacctgaagtttaagaggctgccccttcctgggtacctggccctgccggagagctctgggaccatctagtgggacccagtgcttgtccccaggccatcgtctgtcttaggtgctccaggcttccctgaaggaagagagaacagaggggcctgaggggatgacttctctttgcctcctgggaggaaccccaggtgcagatggctttatggcctggctcagtcacagtagaacgttgaacacaagtcctgccgtggggccaaggtggggctcagcagggctgggcttctcagactggctgcatccaggccctcaagagtgctggctggacctgtgggggctgcagaccctgtgtctgcagctcaggcccaggtgacagtgacatcgcagacctgcatctgaaaatccctgttggtgctcagggtatcctccttcttcctgttaagacagagggacacactttgggctgtagacttgttccatgcacttgggagcctcctcctttggtggtctgggatatgggcagtgaccacgggcaagatgcccaccacctctccacacactgtgatattggggtcaccgtggctagggtcacacactgtggttaggatcagatccgtttccgacccccactttaagaagtaagactgctgggcgtctcccgttctgggactggagcagttgctatttgacttttgcatgaaatgatgaaatccactggagttgtatgtaaatccagcactccgtgtggcaggtgcagtctggttcccagtgagaaacagccacatcacaaaagcagcgtggggcacctgggccctggtgtcctccgtggggtgcagattctcccctgaagtgagagctgggctaatgacactacttgggctctctggagctggggcagtgtggtcaactcagccccttgccctgtggcctgcaggtggctttgtacaagtcagtgccaacgcgcttgctgtcacgggcctggggtcgcctcaatcaggtggagctgccacactggctgcgcaggcccgtctacagcctgtacatctggacgtttggggtgaacatgaaagaggccgctgtggaggacctgcatcactaccgcaacctcagcgagttcttccggcgcaagctgaagccgcaggcccggcctgtctgtggcctgcacagcgtggtgaggcctgaccctttcctcctgcaggaaacaggactttttcctgcctccccagcacagcccccctggtctccagcgtatctggaaggggcaggatgacaaggggaggtgggggctgtctcctggggggaggagaccctgctctccctggcagcaagcctctcctgcccttccagattagcccatcggatggaaggatcctcaactttgggcaggtgaagaactgtgaggtggagcaggtaaagggggtcacctactccctggagtcgttcctgggcccgcgtatgtgcacagaggacctgcccttcccaccaggtgggtcactgcacaggcggggctaggcagccctgctgctgtgtggctggaccgggagggaggggaatgctggggaaggaactgaggctggcatgtggggcctccctgagaatccatgtgcagaccacactcgggctccgtgctgggtgctcactgtgttggtggcccccacgtctgctcctactccacagccgcgtcgtgtgactccttcaagaaccagctggtcacccgggaagggaatgagctctatcactgtgtcatctacctggcccctggggactaccactgcttccactcccccaccgactggactgtgtcccaccggcgccacttcccaggtcagcccggggccagcgtggggggagctgcctctgtgggcttcatatagaggctctcagct

SEQ ID NO: 8124 - DNA, 1148 bp, mus musculus
ggtggccaggactggggacagtgggctttagtgcaggggcttttgcactggactgcaagccctgagcaggtgacctgagcaggtgtgtgaccagtgcctgtctgtctgcaatagccctgaccctctattctgcaccctgtgagccaccgagactgaaccaaacccaggaagcggcgccaccaaccagcctcgcagaggcagaggccctggagcagtgacagcacaggagatctgctggctcgggggaaggggaggaaagaggaaaacaaagggagtgatcgagtgagcctcgccccgccctccctgcgccggcccatgatgtgtcagtcagaggcgcggcaaggaccagagctccgcgcggcgaaatggtgagatgctgcccaccgcgccctaaccccacggttccccgccacgacctccggaaggtcagagttcacatccagcggcctcgcagtagaggtggcggcaaggggactggtggtcagcccccgaggctggaggagcctggcctggggggcctgagcaccctgagtcggagagcccgcttcaggtatctttggttccaaccatgaggagggcccagcagggggaggctgccagcgagcctcagacctcatgcctgcgatcttccctaccctggtgctcccaggccccctgctcgcagcccagacccttgcctctgcaccccacctaggagagaggcttccccattccccttcctgcccatgggaggggtgtagctcttcccagttggtccctgctcttctgcagtgagtggggcaggtggcaaagccagaggggagcagtgatttgtctttgcttggcccctgccaccttcctggaccttttaaaaatacaccggggtgcgatgggagagaaagtaggcacccgggagctgcgtggatgcagccagctctgagcctgagcctgagcggggttcgccactggttcgcctgccgtctgctctgctgctatcagctgagatgctgctttgttccttggtttgctcagcaactgggagagaggactcagcttctcttgagagcacagtcccagatggcagccgtagattagctaaatgcagttactttgcagatgaggaaactgagacctggggacgttctgagtggatggcagtgtggtctcct

SEQ ID NO: 8125 - DNA, 1022 bp, mus musculus
ggtggccaggactggggacagtgggctttagtgcaggggcttttgcactggactgcaagccctgagcaggtgacctgagcaggtgtgtgaccagtgcctgtctgtctgcaatagccctgaccctctattctgcaccctgtgagccaccgagactgaaccaaacccaggaagcggcgccaccaaccagcctcgcagaggcagaggccctggagcagtgacagcacaggagatctgctggctcgggggaaggggaggaaagaggaaaacaaagggagtgatcgagtgagcctcgccccgccctccctgcgccggcccatgatgtgtcagtcagaggcgcggcaaggaccagagctccgcgcggcgaaatggtgagatgctgcccaccgcgccctaaccccacggttccccgccacgacctccggaaggtcagagttcacatccagcggcctcgcagtagaggtggcggcaaggggactggtggtcagcccccgaggctggaggagcctggcctggggggcctgagcaccctgagtcggagagcccgcttcaggtatctttggttccaaccatgaggagggcccagcagggggaggctgccagcgagcctcagacctcatgcctgcgatcttccctaccctggtgctcccaggccccctgctcgcagcccagacccttgcctctgcaccccacctaggagagaggcttccccattccccttcctgcccatgggaggggtgtagctcttcccagttggtccctgctcttctgcagtgagtggggcaggtggcaaagccagaggggagcagtgatttgtctttgcttggcccctgccaccttcctggaccttttaaaaatacaccggggtgcgatgggagagaaagtaggcacccgggagctgcgtggatgcagccagctctgagcctgagcctgagcggggttcgccactggttcgcctgccgtctgctctgctgctatcagctgagatgctgctttgttccttggtttgctcagcaactgggaga

SEQ ID NO: 8126 - DNA, 17522 bp, mus musculus
ctcaacaatgtgttcctgcgccatgaacggtagccccagcacctcccctggcctctggcctactgccccaaccctctcccttcccttcctccctgttctcctggtctcatgccatctgagccttctctcgtcctcctctcaaacacaaggcaggctcctaagggcctgtgccctcagctgtcttcttccaggatgtttatgagggcccctccttccagccgccctgtatctcctttccagggttagcgctgctgcctgtgcccaagtccagccctgggagatggtcacaggtcacagctgagagcacggccctgcaaccagactggcctggtgtgtcctcgcccactccaccacttcctggttctggggccttagacaagtgacttcactgctgcaagctacacaaaacatttctggctaacttaggcagaaaaagaatttgttaggataataatctttattaaatgggtagctttcagaatccagagaaaagtgaaactgatgtctcccaacagaacaagaaagatggatcccagggcagctcagatgtctcaggagcagaaattcctggaccatctccccagggtgctgccatcaataaatacatcagctcaaacacttgtccacaaacacctgtccaccttttttttttttttttttttgaggcacgatcttgctctgtcacccaggctggagtatagtggcatgatcacagctcactgcagcctcaacctcctgggctcaagcagtcctcccacctcagcctgccaggtagccgggactacaggcatgcaccaccacacccagctaattttcttttctttttttttttttctttttgcagagacaggggtctcactgtgttgcccaggctagtctcaaactcttggcctcaagcagtcctccctccttggcctccgaaagcattggtattacaggcatgagccaccacacccacctgcccaccttgtatcattctgttcaagagtcacatccccaagagagacttggattggctgagcttcattgtgcctaccagctggggtatgggagagggccctttgatggcagccccaccgggatgatgtgaaatgggggaggagcagttcctctaaagagtacttaggtgctattacaaaagaaggagaagggctgggcgcagtggctcacacctgtaatcctagcactttgggaggctgagccgggaggatcacttgaggccaggagtttgcaaccagccaggccaacatggtgaaaccccgtctctactaaaaaatacaaaaaaattagccggaggtggtggtgggtgcctgtaatcccagcttacttgggaggctgaggcaggagaattgcttgaacccaggaggcagaggttgcaatgagccgagatcgcaccactgcactccagcctaggcgacagagcaagactccatctcaaaaaaaaaaaggaaagagaaggagaaggattgctgggtctgcagaaattgtgtgcccatcacacctcctctgtatctgtaaaatgaggcttgtggcataagtgagagtccatgaaacagtgtctgtaaagcgcttagcagtccagggtgtctgataactgacatgagttattccagcctcctccagccccttgttcattttttgtgtctttctccatcaaaagacactcactgattgattctaaatcagtggaaagtggggggtaccctgcaggtcacgtctgcctagcttctcctgctcgttggcccagtggaatgaaaggcctcttccctgccattttggggtatgggctgtgaggtgactgaggggccccatctggtagcagctggtaccctcagatatccacagtcattaggcttaatatctgactgtgctttcaagctcgcagtcacttatacccatgtcctaatttgggcttcagcacttcagggaggcaggtgcctacagatactagacaagcagactaaagttcagaaggaacataatttacccgaggtcatgtgataagtgacaaggccacgacttgaacagaccccacactaaagtcttctcgatctatcacaccggcccctaagtagctccataaaacaagattagagatacatgtatctttcttacagcactgaagagagcactaacacacacacacacacacacatacacacacacaaatatgtaattgaaacaagtttcataagacagtccttacctttactgcgtgccatgcattcctattttctttgctgttctaacctattcctgtttatttgtttcatgctactcatgactaaggttgccttataattgatcatccaaattgggacacttttgcaagggaaagaggagcactgctagttacccagggacagcaggcatgaactggatctgtccagggcacaccagacgtgtcatcaccctgatcataacccaccgtgttgatgttgagacccacagtttgaaaagctctgcctggccgtgtgtgggggcctgtctcagtctgtctccataactcgtgtcttttctgtcttgtaggtttgaacggttccgaacaggccagaccaccaaggtaaaagtcttcttttctgtgactagatcaggccctgttcatgggaagaaggagtgccattctcacctccctcccctagtaaactggacagggtggtgctgtcttatccaggcccatagagaaatccccttctaactttttatgtccctgtccctttaaggtaaataaggctgtgccaccacctgatgccccagggtctccccaacctcccagggagtccagttgagctggagccagaggggaggaaggaaattccctgatgcccagtcctagctcctggggccctggtgacagatccctgggcaaagcctgcaagccacagtgcttggggcagaaaggaacgaagctgcagacagcggggatgatcagggcatctcccttcccaccaggccccaagtgaggccgagccggcagctgacctgatcgacatgggccctgacccagcagccaccggcaacctctcatcccagctggcaggaatgagtaagtgtggtttggagggctccagctgagggtacattatggtactgtgggcacccctgcagattttcggggtgcccttgttatatacccacagcagagtgtcagtctggaccccaccttgctggggtcccaggctgaatcttgctgcaaggtggggcactcggggtcactgcccctggcagccccacaagtcctgagccgccttggatctcagaaatcctaccatcctaggattggccctctacactgaattctccatggcttcaatcatctgcgtgagcttgggcaagttccttaaacctcctgagcctctctttcctcctctttaacaggagtagggagctcgtgtatgagaagcgcttagaccatgccaggcccaggttgcactctggctgagtagttggccattgtcactgttatcactgtgataggttttaatataatttactgtctgcttcatgccaagccctaggaaatcattagcaccccattttgcatcactaatgctatactttttgaaaaaatcgactacccatctgattactgtcctcctgcccagccacttccccagcagaatcaatggatagcgttttgactgttctctaacgctcacagcagccccaagaggggtgagtaaactaaagctgggaagaggaagccgcttgcccaaggccccacagccagcagcaggtggcctgcctcgcgcattcccccacccacacgtgccacttccccagcaccaagccctgggtctggcagcaggtagctcagcagcagctcacacacaagcttgtggatgggtctttcacgtggcctttctgtccctgcagacctgggctccagcagtgtgagagctggcctgcagtctctggaggcctctggtcgactggaagatgagtttgacatgtttgcgctgacacggggcagctcactggctgaccaacggaaagagtgagtggcctggccctgccctggtcccctgcagttcgggtggctctcggggttctggaacccggttttatggtggcacaccatgaggaagggcacacggaccctgcttagtaagcacgcccttagtatcccctaagtcagtccagcatggcctgggagccctgtggtcagttgacagactgcgctccccacaggccatgctgggtgggggagggggagcctaatgacccactgtatgccagaatcttacatagtctgatcagagggggaaactgaggcacagagaggggcaggctcatttgccccaggtcaaggagctaatatttggcagcactaggttaggagcctagggctgtctggttccaaaacacagtgtctccaccccccgcccccctccctgcactgtgtaccgcatagtaagccctccaggagcagggaagtttcctgataaatcctcagggactttcaagtcaagtctttttctgttgttccatagccaccgttaatttccagagaagattaagcaggttctgtcagccttgccccagagctggggctctgcccttccctgtgcaccgtgcattttcagggggtactttcagcagcataggcacgtggcctgagtgtgtccaccagggtctgaccccttgccgggacctgcgggagaactggccccgtacaggcttgtaagaggaacagtctgcttgatgttttcttcagccttttgcccactgtgacccccagggctgagctgtgggcagccaggattcttatagctaaggaaagttctagattatgggatcttcccactgaccccactcagctccttagaggtcattctggtgtcttttggaactttgtcaatgggcctccagagagcccagggataacctctccacacccacaaatccaggtccaggctgtagcctgctaggtccttagggctgccctggctgttagctgtatctttctttagtctgggcagagtctgtacttttaagcccaggtaccctgggaccagcagctgttgccatggagttaggggtgctgccgaggctaccctgcaaaggcaagctaatgagtgtgatgggacttgcagccagacacgcccatccacagaggccccagcaggcaacactgctggccatactggagaaccctggcgcctgccctggtcaccagcctggctgaggtatgctgttgcgctgtccttcctctggggagcaggctccgggggacagggaaaagcacacaaggaacttgtcctctagggcctgcagtctcatgggagagtgacatgcaccaggaccaccgctgtgaagggctaagtgctgtcctggagggggcaccaggctctgtggacacagaggagggagcatgcaactctgcggagggtactcagagctggaccaggtgctgggtgataggaaggccatttcaggcactaggaacagcatgtgcaaagtctcagaggcagggcgggagagaggtgccctggctcccgcacagcagctgggaaagatgctcttcacacagggaagggggcaggatgctgagagggtggtggggcccactgggctacagagaggcagttgattttattctaacatgagcaggagggagcacaggaaggatcttttttcttatcagattttcatctttgaaactgccttcagctgagcacagctgaaatgacatcatgcaccttctcaggccattggttctcctgcaggccctccccagggcttggtttccaccctggcagaaaacatccagcaaggtcaggcgtggacctgagcatccatttcgtcttccctttgttctcctgcctggctggcccccttaaatgcttctggtggatcttccagctctggtcacctgactggccttttctgccagcttggtgtccagcccgctcctccctgtacctgcctggctccccacttcacaccagcctgcaaccagctctgccctggctggcagggaaaccagctccttatcagccgctgtttctgctccagccttgaccacagctggcaccgtcacagccttcctgcagccagtcctatccactcaatgccaaggagtagcagggcttctgggcgagccacagcagagacgcctcggctaggccttcacaaaggcaggggtgtccttcccccgctttgtccgcatcttcgtcagtgctgctgtacacagaggccttctctacaaggagcacttagacaagtgtcaccccagtggcccaggtgcagcccctgcccaccagccccactgggaccacctaaggagtgaccctccaccctcctgcactgggcagggggcagcaggccctagcccaggggtcaccacccagtgcaggaggtgcgggcttcctccagggaagtgcttggccctccaccaccacaggcatggccttcagggacagctgggcttcagggccatgtgtgggcaggggtggcgaggagctaagcttaggaagggcagatagttcttttttttttttttttgagccggagtctcgctctgtctctcaggctggagtgcagtggcgcttgcagagtgcaagctccacctcctgggttcacgccattctcctgcctcagcctcccgagtagctggggactacaggcgcccaccaccacacctggctaattttttgtatttttagtagagacggggtttcaccatgttagccagcatggtctcgatctcctgacctcgtgatccgcgcgccttggcctcccaaagtgctgggatttcagccactgcacctggcccagatagttgttttgagtgaagggaaatcatgggtttctgcgtgttctggggctgggcatggcttcttcagccttgcccacaatgcgccaagcatgtcttagagacagcaacaagcacctccagaccctcaattagcaggccttctctgggtcagaagtcagcaacctgacgccccacctcccccgccactggctttaaggttggctccagcagggccctgccgtagtcactggcccacttgccatggatgggagccgtgtaaccagggaatgccccagctagtggtcacactccaccagcaaactctgcccctggtgggaaggaacagacagcagcactcttcaaaatgactgcgtgggaactgggggtcatattcaagaagcccctttcagtgccagcctactccattcctcagaaagcaagctggtattgcaagagttaaatgtgatgcagtcccagttcctgaagcctacagttagaccagccccgcttcactagcgtgtcaggtggccttgttcctaacaggaatcgcaggcctttccctttgtgaccagaattctgtggcttacttctttgcctcaaagctgcactgagccagtgctgaagtcctgtctgccggcagttcagggcgagaataacagggctctttccctgcaacagggctgggtccccaacacctgccctgggcacccccactgcggcagctgggaaagacaccatagccgcctctcctccttagccagcttctcctctcactcaggttattctcttgctccccaggagacttaacctcacacacaacatacccttccttgcctctcctcatctgcccagcaactgtggggtcagcctctgccgctcccagcccatcagccttgcgtgccctcccagttcctgcctccccaccctgcctagctggctggcaccccccagaggacatttagaagagctgtaaccaagccacctcccatgctgctgagacaaggtgggggcagagtcatctttgtgctggtgagccagtgcaagacaagatggcacctcacccagcagtttatagatgtgttttcagcagcagaatggaatcccccattcaaatacgacctcatacacaaccacagtctataaaataggaaacaagatctgctcaagaaagggtctgctgggaattctccatgagcctacgggcactggagctatttatcagtctcctgagtttggccaatcctggtcatagccattggtggtcttggtctcagtctttggccagcaacaccctccctaacctctccagcctttgctgctgtctgtcatgtaggtcacttgtcagatcctaatttccagaggcaggaaatgagaccctttttaccatttccaggcaggcctggaggatgggagccgtcaatctgtgccccccagcccgctccgttcttgcatcagccatcggtaagggcagcatccaatggcttggtggtctctctttcagggtaaaatacgaagccccccaagcaacagacggcctggctggagccctggacgcccggcagcagagcactggcgcggtaagcagaggggccatcctgccaccctggggccctcctgaaggaggtgagggaatgctcacccactgggtgccgttgtgggccaagcactggcccagcacgtccacaggcccttcctcgtttggccgtcaggtcggttctttttggctagtgtggttattcccagtttatagctatggaaactgctagagaggccaggccatttgcccaagcccacaagcaaggattcagacctgagcctgacttgaaactggagaccaggccgggcgtggtggctcacacctgtaatcccagcacttcgggaggctgaggcgggtggatcacctgaggtcaggagttcaagaccagcctggccaacatggtgaaaccccgtatctactaaaaatacaaaaattagctgggcgtggtggcacatgcctgtaatcccagctactcgggaggctaaagcaggagaatcgcttgaacccagatggtggaagttgcagggagcagagattgtgctactgcactccagcctaggtgacagagcaagactccatctcaaaaaaaaaagaaagaaactggagaccagtggcccgggcttcacattccagctctaccagttaccagctatgtgtccttaagcaaatgactggcctttctgaccctcagtctctttatctgtacattggggcttatcctagcacctatacttgtttataatagaagtgtgagaggatatatttagggagctttacatggagttagagcccgttcaatagtattcctctctgcctctctagagacttttaatctgcaggagtgtgggcagagaggaataaaagagcggaccctggccaggcgcagtggctcacgcctgtaatcccagcactttgggaggccgaggcgggcggatcacgaggtcaggagatcgagaccatcccggctaaaacggtgaaaccccgtctctactaaaaatacaaaaaattagccgggcgtggtggcgggcgcctgtagtcccagctacttgggaggctgaggcaggagaatggcgtgaacccaggaggcggagcttgcagtgagccgagatcccgccactgcactccaacctgggcgacagagcgagactccgtctcaaaaaaaaaaaaaagagcggaccctaaagcagcggggagaaatgcgagggtgctctttgaattccgtttagttccttgactgtgtgttgagtgacagccacttgtccagcaccgagcacattttgtgggtgacccccacacgctttggcaagacctccaagcaccattctctcatgcatgtcaacgtgtatctggatgcttttcaggcagtgtgagaatttctgctccagcaagtgagcagacagagcaggtcccatgggagacagttagaaacagccggacctgggagtccagggagtccgggggagtgagggtggtggacctggggccgaggaggctagaggaggctcaaggcagcatggggacttctgaggctagcatggggttgggggtaggaagtgaagctctatgggtatatagcagggaccagaggacctcagcgcggctaggagcgctgcagattgcatcctaagtgaggtggaggccgcggggaagtcttgagcacaggagggacttgacttccaatctgaaagatcaggatggagctaggaaagcagggagggccgggcacagtggctcacacctggaatcccagcactttaggaggccgaggtgggcagatcacttgaggtcaggagttcaagaccaacctgggcaacatggggaaaccccatctctacaaaatatttaaaaattatccgggcatggtggcgcacacctttagtcccagctactcaggaggctgaggtgggaggatcgcttgagcacaggaggtggaggttgtggtgagctgagattgcactacgacactccagcctgggcaatggagtaagaccctgtctcaagaaaagaaggaaagcagggagggacgagttgtggaaaccgtccaggccagtccactgtgggcaaagtcttcgtgacccccaagggcactctctccgctcctgggtctcccagcatctcaggagccattcccaagtcagaacagggcaaggtggaggacgctggggtgggccatctgggcctctcgtggacagaggttgactctaccacccagtgggcaacaagagaatccagtacctcccatgtgtggtgtgtgacctgccaccaagcacagcacattgcacacccgtgtcacatccaccgcacacaccagtcagagactccagtcctttttcgggtgtaagccatcatttgctgagcctgtgctccgggccaggcctgcactaagcactttgcatcccctctcttagtgagtcatcacagaaacccttagggtatgttattatcccgttttacagatgagaaaactgagttccaggaagagcttaagtgaaaccacaggtgtactgtcctcggtatggtgcctggcacacactacggtattacggcacttacgcttcgcagtaccgccatgtcctcatcccatttacagatgagaaaactgaggctgaggacagggagataccctgcctagggtctcgtaggtattgttctgcctggcttctaagccatgctggtaaccttagagctgtgaaaagccctaaggtgcaaaggagagtgagtggaggtgtgtgtctccctcctcagcctcaggcttccagtgtgtcgggattcatcggaaccaacacaccgcgagcctgctgtaggagctcccctctcaggccacctggcctctcgtggtcagaggttgactccaccacccagtgggcagcaatcccagccaatctgctcctgctgcagcccagagacagggttcacttccctaggggcacacagcaattcaggcgtgactaaaactagagcccaggtgtcctggctcccacactaccttgcagcccgcccacagggaggaaacgcaccacacaactccactggcagcaaagagaagctgataaaccggttatcactgatttatctccgataacctgggagatttaagccacttctgccaaatcagggtatgatttcttaaaactctgtgagcaaatgcctgctcctggggtgctggagtttggctggtggtaaggccttcacccactaaaccgtgagaacatgattcccaagagcagagtacaaaacagcatcaaaaccaggcgcggtggcaggtacctgtagtgccagctacttgggaggctgaagcgggaggatcacttaaacccaggagtttgaggttatcgtgagctatgactgtaccactgcactccagcctgggcaacatagtaagactgtatctcaaaaaaaaagaaacagaatcaagtgccaattgtgcgcagcccaggtttgcgccctgggattcagagcaggactcacaagtcgtgtgacgaggtggtattgcatgctgtgtgccaggttttagttccttcactccctgacatgcctgctgtgtgccctgtgccatgtgccaggccccatgctggtctgagtagggtgaaccagccaggcacagggtgacgggctgggagcaggactctcgtctccctccactctggggccctaggaaactgcatgtgtgccatggatgaatgtgagaaggttggataaactgatgtttctaaaacctgggtgcctgtcagaccctactgggagcccccagaccatctgacagccgcctgccctgctatcctggggttgctgaggcccagcctctgggatccttgtggagagagttgagaagctttgtttagtttgctgtcagctctgcctcagcctacccagggcgctggcatcccagagctgttgtggctcaccccccggtgggtaccacaatacctgcctcatccctctacaccagccgccacatccaccacacacacctccacacaccacacctccacccatagacctacacacacaccacacacacatctacacccaccacacacacctccacacacacctacactcatacacctacacagacacccctacacacacaccacacctacacactcatgcacctacacacacccctacacacaccacacacacatctacacccaccacacacacctccacacgtcatacctccactcatacacctacacacacccctacacacaccacacctacacactcatacacctacacacccccacaccacacacacatctacacccaccacacacacctccacacaccacacctccactcatacacctacacacagccctacacacaccacacctacacacccatacaccacacacacccacacacaccacacacacacatctacacccaccacacacacctccacacaccacacctacacacaccacacctccactcatacgcctacacacacacccctacacacaccacacacacatctacacccaccacacacacctccacacacctccactcatacacctacacacacagccctacacaccacacctacacacccatacacctacacacccccacacacacaccacacacatctacacccaccacacacctccacacacacctccactcataaacctacacacacagccctacacacaccacacacacatatctacacccaccacacacacctacacacacacattcatacacctacacacacccctacacacatcacacctacacactcatacacctacacacaccacacacacatctacacccaccacacacacctacacacaccacacctacactcatacacctacacacacccctacacacaccacacacacatctacacccacacctacacacaccacacctatactcatacacctacacacacccttacacacaccacacctacacactcatacacctacacacacaccacacacacatctacacccaccacacctacacacacacccctacacctacacatacacacctacacacaccacacacctacacctacccacacctacacctacacatacacacctacattcatacacctacatacacacccctgcatataccacccctacacactcatacacctacacacctgcacacacacccctacacacaccacacacatctacacacaccacctacacacaccacatacatctatacctacacaacctacacctacacatacaaacctacactcatacacctacacacacacctacactcatacacctacatacacacccttacacacctacacacacccctacacacacacgcctcccaaagtggcagcaggcctcctgacccgaaaggcgcacccctgttagaagccgcgccctccagtggccctggcgctgccgtccctccgccatcagcgtgactctctctcacccagatgggaggcggctgcgggaaaagcctcagtgactggatggtgagacaaggcatggtgagcaggggccaggcccggccacccggaaagctgggggtgctcgcagggctcctgccaggcatgggcgtggggcaccgtgctgctctccaagggagtgggacccaggagaaggcccagaggagcaaggaggggcagctgagggtcttgcgggaccccagggctcaggctgtttccgggttggcccggccagcccagcttccgcagctcctctgtgcccggttcctgctcttgagtctcgggcaaggacaaggtagcccgtctggcagctaagaggcgatggggatagcggagcgggagacggagccggtgtgcacagctgggcacttgctgttgccactgctgctgggaagtcggctcctgccttctctctgggctctgctcctgcctggggggtcctcaggtgctgggtgacagagcttggaaaccaaactggcctggttggggaaagactctgtctgtcttttccaaagtagctcactagtaactagtgctattagtgccattactgattaatagtaaataggaactggcctattggtttcttgagcatctcctccatgccaggccctgtgctaagcttttgacatcccatttcatcctcacagccacctggacggtaagtactgctgctagcctcaccctaaggacgagggaaatcaggcgcagagaagttaagtaacccactcagagtcacactgtgttaaggggtgagctaggtccagctctttctcactctgaagtctgtgcccatgacctccaactggagtctgcccctgcagaagccgttagagaggaaagcctccaactcctgcccctgtgtgggagccatcgtggcacagcccatgtctttgtggccgaaagtgaaatgtccccatctgtagcaccgcccctctgggtctacccacctggccttgtctggttaacttcgcgcctctgctctcaggccctgctatgcccccttctatcatgaaatctgcgtctgcagagacaccaggggatggaacctggggacccctggcccactaaccatgtccccatcccagccttcacggctggagaaaatgcctggggtctgaccctgggcttggcgtgtcttttgtcagatgctcctgagcacctgcagcatagcccctgccccaggccattgcccaaagcccctcctccagcctagaatcctacccgaagggtgtgtcggaactggggttcttctcttcaaggggaaggagctccctctgacccctggccctgctccagctgctgggagcctggtcccctgcttagtctcctggctctgcacctccatcacccacagcctggcacagcgggcccagtggtgggtccgggcagctaggcagctgaggctggggtgggaggctgcccagggccacccagctgcagggtgctgagctggcacgtcttccaccttgtcacctagggcactgccttaccctctgcccttccttccagatcccagtcacccaggcctgcctcatggaggacatcgagcagtggctgtccactgacgtggtatgttggggcccactcctcacccacacagcaggaggacccgttgttctcaccaagaaatgacccatggggccagggtagacttatatagcatatagcaccctgagagcagaggggcacacttaaagtccccatctcctgccacctgcccaccttgtgtttggcacgccccccagagaagtcctgggcacagtagcctctcggctgcttcccagagcctgctcccaaggtgaggtcccagtgggtgtcagcccaccttagggacatcaggccaggctagagaggctaaccgaggaagcataacagcgccaggctcttacctgcagtagctcagaagactccagccacttgcagagggaacccatcaccaccctgtttacagatcagaagaccgataagcagctgtcctctaaggggaagcacccaggaggaggagggcgggtgccagtcatggggaccccaagccctgccaccctcccagggagcagaaggggcagggccagactcagcttctccgtccagggctcctaccgcagcatctgccaccccgtctctgggcaccaaggcccacatgggcacttcaggcccagaagccgccttctgcaggtgaagagaccatttctgcccaggactaagccacagaccaaggactcaggctttctgtctggtggcagaagcctcaccccctccctagtttgcagtgttagcatgaatggccctcagcctctggatgtcagcctttcccccccaggggtgaggaccacccaccccttgtgaccctccaaggaaaggaaccagcactcatcaaggtcccactgggcaccaggtgctgggcttggcgtgctgtgtgttatcccatttcagcttcccagcaaccctccaagttagcttcagcccccaccccgcccccattttacagaaggaaaacacaaggctcaggaagtcaggtgccacccaaggaaggtcctacggctcagggaggagcccaggtccaggtcctgggacctgggtggtgggggcgtgcagagcctgagctgggacccagtgctgaggttcagcggggcccgagctgcagcaccactgccccaggctgaccgtactgggggcccggctaacctctgcctcctttccttctaccttcccagggtaatgatgcggaagagcctaagggggtcaccagcgaaggtagtagtccccgcccctgcccgccctctcctttccccagggctctggcctcagggcctaccctcaccctctccccttcctctagaatttgacaaattcctggaagaacgggccaaagccgcggaccgattgcccaacctctccagcccctcagctgaggggcccccgggtcccccatctggcccagcgccccggaagaagacccaggagaaagatgatgacatgctgtttgccttatgagtgtggggtctggcaccctgcagcccaggtccccactgctctcacacccttaggctgggacctccctccctcctctggtgttaaggctgctttgggggtggcttgttacccccttttcctcctctttgaagacggagctgccccagctgtggctgggggtgtggaggcagtgggatgaactgggggacaggtctgcgctgcagtgggatctggctgctctgcctcctttcccaccccagctgaccatgagactttgctgagaagtggaggccccaggacaggctggctggctggctggctgcttgacccagtgtgactctccttcactgagtgataccctgctccgggcccatgccccaaggagcccttcagagcccacactgccagtcgaggcctggctggaggctggccacagtggaaattctgccgagcctcttgtcccttccctgctctgctgcatggggccccatggctttggctggccactgagggtagggtgtggaggtgtggaggccccctgaggagctgcggcggcccaggtacgaagctgcaactctgcgcgcagtgggcgagatctcatcagccccaggctgcaggtgaggcttcaggggatgctggggccccactgcccctccgctgccttgccctccatccttcctctgttccttctggccgggcaccacagcactggggctcacctcttggttgatcctcttgtactgggagaggtgccttttgtatccccaattaaaggtagaaaacca

SEQ ID NO: 8127 - DNA, 17522 bp, mus musculus; identical to SEQ ID NO: 8126

SEQ ID NO: 8128 - DNA, 17522 bp, mus musculus; identical to SEQ ID NO: 8126

SEQ ID NO: 8129 - DNA, 1029 bp, mus musculus
gaattgccttctacagaggcgaattatattctgtagaaactagctagccaccaagatgttaccaataaaggattccttatactagcaactaaccatgtttaaaaggccttagccatttagagtaatatttatgagtacaagcataattggttccttgccttctacagataatcatctataaaatgataaaagcaggcttcaactgtgtttcttctctggggtgagaaggtgcagatacacatgggtgatctactgatttaccttctgaaagtactctttggaagcagctggatttggcttgattgtaggagaatccagtgtccagtttgctgggcagacttctccatgggtttctacatactggaacgccttcaccaagtggagggtttcttccacgcttcggcccactgggaggtcattgacgctcaagtgcttgatgactccattggggtcagttatgaagagacctcttagtgcaagaccagaaccttctaacagcacaccgtagtctcaggaagtttgctcaaatctgacaagagtgggatgttcatgtggtccaaaccaccattatttcttggtgtatttatccaggcaagatgactaaagtgggaatccactgagaccacaacttcacagttcacatcatgaaattccttagctttgtcactaaaagcaacagtttctgtaggaccacgaaggtgaaatccaaaggatagaagaaaagcaccaaattatttccccttaaagtcatcaaggcttaggtctttgaactctccattgacaatggctgtacccttaaaatagggtgcatgctgggcgacagcaggtgcatggtatgaggagctggtgctaaagaattttgcttgactggaaccagaccataatatgtttgtcaagctcgttcttccagaagcagcaagcttgagggctgcagtggcagaaatgccccaaggaatggcactcacatgtcgggcagccgatgctcagagtagccttcccacagcagctaccatcttcagtgcacgcggg

SEQ ID NO: 8130 - DNA, 562 bp, mus musculus
tgcttttaactgggggagggaaagtaggaagagagccttatgtaatgacttttggttcttctcagccacttaggattggcatatctgcctttggcagtacagggccaggggtggggtgatgcccatgggagcctgtctgcacagggagggttggctagcggatctaggagggaattagggcgttccttgaaatctttgtgttcctaatatattttggctgtgagttgggctacacgctgctatcactaccccctcaaaaaaaccaagaaacaaaacgccgtagagttaatacttcattcccacaacatatactccctatgcatcaaacactgcacaccctggggatgcagcagtgaatgagcccaaatgtcccccagaagcatatggtctgggggttaatggagtggagatgggaacaaggtgtggagcaagtacctaggacccctgtagattagttctccgcaccgcgtgatctcagggttcaaatcttggtcacatactttactgacacagtgaccttgggtcagttacagaaactactcagtttcttcatcctttaaat

SEQ ID NO: 8131 - DNA, 1087 bp, mus musculus
ctcctttcctgcacgtccccccgcccccgccctcgctgcctctctgctttgccctgaacacccccaccttggaggttcctgggattagccccttggcgaggatgccgagctggccggcgtgttgtgttggctttgcgtgcgccacgccgagaggctgactgtcttgggccgcgggaagtgggctgtcattaaccactggctccgtgtttgtcccttacttgtgttttagagaaggatgaggctgcaattgagcgctctcagttcaatgccacgtcagtagctgatgtggacaagcgggtgaaacggcggctactcatgggtaacacttttcttccacttcctttgtcgtacttgcacttgtgtgtgtgtgtgcacatgtgtgtctcgggtgcgcactggcatgtggacatgggcgtgtgtgtgctgtgtgtgggtgtgacgtgtgcgtgtgggggcatatgtctgtgttgtggggtgtgcccacgtgtgtgcagtcctgcgtgtcgtgtgagtgcggggggctccactccaggtgtgaactcactttttcctttttaaagtttttaccctccatcaaacacatttgttcgttgtttgtgtgtttgtagcaaagaacccagggctagtatccactggcctgtgcgtgtaaggagacgtgtgtcgtaaagctccccgacttgcgtgaacacccacattcacagttaggattcccaggctcagcaaagcagcactgagactcagccacaaaagagggcatttgagtagacgggtcagggcaggagagtccttacccatctccactcctgggagggaagctaccggccaggacctccaggacctctcagggaaaaagccacctacttctcagaggctgctcaaggtgttttgggaggcctgctggcagggctgatcaggcaccgatgtgaggagaacgagaaggaagaggagaaatcactgctcttggacagagctcagcgtgcacagtggaaagcagacttcctcatctactcgttcttctctatcagtcggttctgctgttttgctggcctctgggctttgccagctgcccaagacctcctgagcgtag

SEQ ID NO: 8132 - DNA, 490 bp, mus musculus
tctgggcagcccacgctgccatcaccaccattgcagtgctctttgtagccactgggtgtcagtgtgccctgagaagtcaacgcggcttttaggagctctgttgaattgaccctttctgaaataattttcatatgaagtggttacatttacctttcagctttacttccgtctcttcaggttaaatctaaaaaacacgtttcagagattaatttcaaaatatggtttattccgggaggaagcagcatcctaagcacgtgacatttaaagaccaggctataaggaagtgcctctgcccccaggccaggtggcagctgttcagatgtttattatggacagtgagctctgaacggggtcagcctggcaccccgagtgtggaagacattttcgctcagtgtgaggccttgtttgaggttggtcatcaatattggaatttcgtgaagttggagtgaggttgccagatttaatcttcatttctaaaatttggtagctg

SEQ ID NO: 8133 - DNA, 1214 bp, mus musculus
ttcgcagcaattacaccgccttgttgggagtgtggatctatggatttttcgtgttgatgctgctggttctggaccttttgtattactcggcaatgaactacgacatctgcaaggtctacctggcacggtggggcatccaaggacgatggatgaaacaggacccccggcggtgggggaaccccgctcgggcccctcggccgggtcagcgggccccacagccgcagcctcccccaggcccgctgccacaagccccacaggccgtgcacacattgcggggagatgctcacagcccaccgctgatgaccttccagagttcgtctgcctggtgagtggctacaattgagacccagaatgatttgggtcattgtctttggagagcttggagaatacgccatcactctcgccatagtgtttggctcattggttgcctgattgtttgcttatcttgttgtttgccaagaaaaatttcaaactgttatgggtagcctacaacacatgcctagacaggaaagtcaaaatgagaggtggaaacagagcttagaagcaaagcttgcaagctcattgcgcttagagcccagtgtgagagaggtaaccactaaacatttagtggagttttgggttacctagctgccaaggcaaaggggaaaaccggatggctttttgagttgtaaatctggccaaaggaagcaaatcagtctgtccagccagatttttcagcatgaggttagaaaatacaaatgttacttagttccttatgtgtacatgccttgtatggcatgaggggtactagttctgactcaggcaggctgtgaaggaaggaaggaaggaaggaaggaaggaaggaaggaaggaaggcaggaaggcagagaggtggcatctcaagggttggccttgtggggtggctgccccagggttatgttcagatctgagcttgtctactgcaattcccatttccgcccagttccagtatggtggggatgggcctgacctaatcccaggcggccctgggtagtgcagcatctagagttggaaagggagaggcagggtctgtgcgtttggagcaggaactccctgggaggctggctagcaccaaggacaggagccagactgagggtcgattcccaggtcaagggctagagtgagaggttcggatgctctgtgggggctgagctgcagccatgggcacacagggctcagggcacgtcatccaggga

SEQ ID NO: 8134 - DNA, 2940 bp, mus musculus
tgaaacaaagacatatctgactgttgcttgtggaggtgcctgccattcctccctacagtgattcacaggctcacccagcctctccttctccttcaagccccaaacctctgaatgccaggaagggtggtaagaagtgtctctgcgcctagtaccagtaaagttggcaggtcactgtggctagcgggggcaccattgttggcctcgggcctggggagagaaaaatatgacatacagggggcccacgggggtacgttaggttcagccctgtaagcccacactgaccctggtgggcagacccagcccagggaggggcaggcaggagtgaccccgtcatcaggttctgctggcgagcccagggtggtgacaggcgcacgtcttttgccgggagctgaagacgttcatgggctttcaagcaggacaaagcttcaatgtcatcaccaggtagcaggcagagcaagggtgctgacagcctgcagaagcctgtgcttatctctccatcggagctaaagcccatgtttgcttagggaacagcctgaaattccaccccagctgctgggcctttcacttttgaaacataagcccagagagcgaaaggggggaacgttgtgcccagattctctttctgagcgtgaacttgatgttcctgaccaggaaccagccactcgtaccgaaggccttcctgacccctcagttctcccctgagcctttgctgtgtcctgggcaccaagaggtggagataggctgtcaccgtgcacgtttcctaagcctgcagaggaactgttcacagaatccagcctggaatcagccgtttgtggcaaacagtcagtagctatttctcaacttgtggttgtgaagctgcaggctccatattcgctcttcacagagcatccaagcaggtgtctcagtgccagctcacaccgttcacactgctcacaccagctctggagagctgcttgtacacatctctccacaagtccactttcagtgttgccacgtggtaccggaaatttgccatagaaattggccgatggtacgaccagagagccacctgttagatagttaccccacatccccaccctcaacaccaccttagacaaatcctactgtcagaacatgtggaacggagaagggaccttggcggttcattcataaatgtcagcacccataggtctgtgcctgtttggccgcagacactggggagcagcctgtagccttggcttgtgcagcttcctctgcaggaggggtgcctcttccaagaaacctgtcctgactccccagccctccccacctccattctcgcccccgctggacaatgcacaccctccatcagagcgtggtgcatacctttcatcctagatctcccaccagctttgaaaccagcatcctgttcatgatgtctggaaccctgggaactgtcccagcacctgtttagcacatgtgtgcatgcgaaggggatctgctgagtgctctgctctggtgggaaggccgctctgcacagctggagctgatgccttggcagatgctgggcatctgaatcgtgcagtgcaggagcacaggggcatggcaccgtttgttgctggggaacctaggcctcaaaagggcctcagcctctccgcagtgcagtgaggactgtcccatactctcactgcgtacagagtatgggagagtctctgtgaggctttgggtgccctgcagagggaaggcagtgccagctgggcctggtcgggggccatggagatggcgggcccaggctggggaggacttgtggcacccactcccttacccgctaacccggatcccctggaatctgcagaatgcctggggttgctcctcttctaccctgccgtggctgagctttgtctgtgccctgtcctctggccacggtctttgcctgatccctaccctggtacaggcagagctccctgcaacccccagctgtttccccagaactgacaccagtctccctgcaccacccatcctccttttgactgccctggggacgccactgctgctctgatcctctgtcactccagccacctcttgcttccctgttatcacaaacactgaacagtgagctcaggtgtcagcctccacagaggcatgcacagcaaggggtccggaggcatgccccatggagaactgggggtgctctgcttgcaggaggatccagggcccattgcagtcctcagatgttctgggggagaggatacgcctgcttcatttcttctcaggggtcagaactgggcacagggggttggaaggagggagaaagatgtctatcaggtacccactgcatgccaggccctcttctaggctcccttaaaacctttcaggtaggccagtcacggtcgctcatgcctgtaatcccagcactttgggaggccaaagcgggtggatcacctgaggtcaggagtttgagactagcctgatcaacatggagaaaccccgtctctactaaaaatataaaatgagccaggcatggtggcacatgcctgtaatcccagctactcgggaggctgaggcaggagaatggcttgaacccgggaggtggacgttgcaatgagccgagatcacgccattgcactccagcctgggcaacaagagtgaaactccgtcgcaaaaacaaaagacaaacaaaaaacacctgtcaggtaaatggtggtagagcagaaaacctgggctcagaagctggcattgatcccagagccatccagtttcaaagcccacacccacaactttcctccaggttgggcagtgcatgatggaaaggctgtcccagcaagtagtgagttcactttcaccagtccctggaggcaggagcagagcctgagctgaccacttggaaggagatgttattcaggggactcgagcatctggcgtaggatgggactccatgaggtctatgcctccttctagctctgaaactcctcaagggaaacc

SEQ ID NO: 8135 - DNA, 1107 bp, mus musculus
cccttctccttattttgcatcctggggttccagggacaaggtccctcccgggccgcctcccaccctacgcacttctgagcctcaagggcacccggtcccgggtcccgggtctagaccggctcatcgcacagagtagcagagccgggctcatcgaggaggcaggaggggctcgccagcgtggcacgggcgcccggcgggaacctccacccgccccgcggccgcgcgtccccgcctcgaattcagccccgccccggtgcgccgggctggaggggcgctgacgctcagcggtgtcccatcggtgaccttggacggtccctccacctctccggcctcagtttcccttggctgcagcggccgcggggcgctaggtgggagccgctgagcgctcccggggccccgcccaccgcgagcagccaatcgggcgccgccctccggggggtgtgtcccggggccgaggcccggggcccggagggcgcgcggggcgggcggggcttccgggtcgggcctcgggacactggctcgcgcggaccggggcagggggcgggccgaggggcggtgcgtgtcgcgggggcgcggctggcacggacgcgcggaggcggcgccgggcatgggccgtggacgcggcggccccgcggcgggggcagcgggcggcgggggcggaggcggccgctagcgccctgcccggcgccgcctccttcggcgttcgccccacggaccggcaggcggcggaccgcggcccaggtgcccgggggcgggcgggcgggcgggcgggaacgcgcgcgggggtccgcggtccgggcttcccaggtcccgggacccggagggcggcggacgggggaggggcaggggctgggcggcgcatgcgcggggcccggggtctcggggtctccgggtcccggggacccgggggcccggggtgcgcggctggggacctgagggcgaggagcgaggacacacaccgaggactcttgcgagggatctcggggcccagctcggcctccctcctagcgctgggggcctgcccggaacccgagtccgcggctgtccctggggtttggcgctgcgcggaggtcgggtctggggaccgcagcgactctgggtcttcgg

SEQ ID NO: 8136 - DNA, 1142 bp, mus musculus
tgtggccatggcagagcccttgggcagctgaggcccgcagcctccctggcctcatcgcccatagcccctcctgtggcttctgatggaatctgcaggggaggggcgctgagggcgggtggcccactccatcgagttaatgcacacagcagccagcaaagggccacatccatcgtgcaggcgcagacaccgagcagagccccaggaatcaattaccaggaggccgcagaggctcactgggggctggctctggccacagaccatcatgcaccatcccatttaattctcagcagccagtgaagggtccatgtgaccctgcctttgatggtcagcgcctccaggggtgggaggctgagcctctgcccaaagcggctcagctcaccccggcagctggaggtgggcccagtctcctgaggctgaggcccattccccctgctctgcttcctgcctcccccaaagaagacatctctgcaggaggcttgcagcccaccttcgagggcagagcctgggagcccgtcctccgggggactggagcaggactcgctccgggcacccttcctcctgggcttctttccaccgtgctatgttcccggctcactgaggccggtggtccctgtctctgagtttatcagtggccatgtgcaaatatgggccatggtgactgggcttacaaagccaaggtgtttaacctgggctggcaaatcgggagggagaggggtaaaagtgtcattcagtaaagaaggccaaataaggatgggggatttgagctgatttccaactgcaaataggcatcaaatccaggggcgacataagggagaggagttccaagactgaggtggttctagggtgtgggatctgtggccagtggtgtgctacagaatcaaccgggccaacatgttaagtccccgacatgcccctagcacactagtttgggtatattcataggtgctatttttaaaaaattagtacatgatgagttgaacagttaaactgactttttaaattgcagaatgtcttggagctcttgcaatactagtgtgcacagtcatctctaagaaaggggcattgcctgctctgattcacaaacttattaggccaggaaccctgctttctggtgtctcctgtgggatgcttctggaagatac

SEQ ID NO: 8137 - DNA, 992 bp, mus musculus
atccacagttcaacctcactccttccttacttcccgccccgcctggcctggttttttgcttctctccttgccttacccactcatcatgacgctcattttgaggtgaagcttgtttatgtccatccaatgcaagcccctgggggcagggcttgtgtctctctttgttccgtgctgcattcccaggaggcagccaccgtcaggatggtctggtgtctgccttggaaggagggaacaagaggactggatgtcctggtgctcagacgccagtgccccagaggctggctgcctgttgacagtgtgggtgccccagaggctggctgcctgttgacagcgtgggtgccccagaggctggctgcctgttgacagcgtggatgcttggtaccagtgcctctgggtctgcagccttggccttggccttccctgacacaaagcccagcctggcccaccgtggacacacgcagagacccaggcatctctctcagcccagagcctgggagggggcagcacagggagcagtccctggacacccagagtgacttcaaggagctgaatcttattaaagaacagacagcattgaaaaacaatttgatgtcgatgaatgttcacccccgccccctccccgccacgcattttaacagccactgacactgcaccttccaaatccgttttattctggtttgaacagctctactccatggaaatggcttaatcggattcctctgttccttccaggcaggcaatccagggtgctgtgtttactttccagacttgctagactgtatgaaaacagacagcttgtacctgtgccagtgtggcgtctgtattttgggcagggatcgaacataaatagactattttgagggtgcctggccagacttttcttccttccccaaaccccatgtgccaaatctttctgcatgcagctaattctatagttagtacttgcctctctcctatgatgctattatttaaagcttgatttctttggagaa

SEQ ID NO: 8138 - DNA, 1081 bp, mus musculus
gcccggggacggggacagcaaaggagactcgtttggaccctgagccaaagcgaggccctgtgagcctgatttgagtggaacccgtacccgggcattacgaccagagaacagctggcccaggccatcggcattccggagcccagggtccagttttggtttcagaatgagaggtcatgccaactgaggcagcaccagtgggaatctcggccctggcccggaagacacggccctcaagaaggcaggcaaaagcgaaccgccggcacctgatcccagacgactggctcctccgagcctttgagaaggatcgctttccaggtattgccgccagggaagagctggcaagagagacgggcctcccggagtacaggattcagatctggtttcagaatcgaagggccaggcacctgggacaggctggcagggtgtccgcgcaggcaggcggcctgtgcaactcggccgccattgggtgtcaccctgatccctcgtgtgtcgccttcgcccacaccggtgtgtggggaacagggcttcttgcacaccacgtgtaatgcacgcctggggctcttccacaggaggctttcttgagacagggagtgagggccgtccctgtgctccagcccagccaagccgcgccggcagaggggatctcccaacctaccctggcatgcggggattttgcctacgccaccccagttcctccagaaggggcgctctcccaccctcaggctcctcagtggcctccgcacctgggcaaaagccgggagaaccgggacccacagagagacggccggccgggtccttgcgctgtgggacagcctgggccagctcaacggggccacagggccaaggtgagcttgcgccacccgcgtcccaggtgagtccgtggtggggctgggccggggtcccaaggtcgccggggtggcatgggaaccccaagctggggcagctccacctcaccagcccatgcctccagaggcctccccacagcaggggcagatgcaaggcatcccggcgctctcccaggtgctccgggagctggggcgctcttctgcactcccctccggccagctgctggatgagctcc
